United States Patent Application Publication US 2022/0348908 A1 - sequence listing, part 2

SEQ ID NO: 2501 - protein, 209 aa, Artificial Sequence
  source: /note="Description of Artificial Sequence: Synthetic polypeptide"
  MOD_RES (1)..(9): Any amino acid
  MOD_RES (11)..(12): Any amino acid
  MOD_RES (14)..(18): Any amino acid
  MOD_RES (27)..(29): Any amino acid
  MOD_RES (31)..(37): Any amino acid
  MOD_RES (39)..(40): Any amino acid
  MOD_RES (42)..(46): Any amino acid
  MOD_RES (55)..(57): Any amino acid
  MOD_RES (59)..(65): Any amino acid
  MOD_RES (67)..(68): Any amino acid
  MOD_RES (70)..(74): Any amino acid
  MOD_RES (83)..(85): Any amino acid
  MOD_RES (87)..(93): Any amino acid
  MOD_RES (95)..(96): Any amino acid
  MOD_RES (98)..(102): Any amino acid
  MOD_RES (111)..(113): Any amino acid
  MOD_RES (115)..(121): Any amino acid
  MOD_RES (123)..(124): Any amino acid
  MOD_RES (126)..(130): Any amino acid
  MOD_RES (139)..(141): Any amino acid
  MOD_RES (143)..(149): Any amino acid
  MOD_RES (151)..(152): Any amino acid
  MOD_RES (154)..(158): Any amino acid
  MOD_RES (167)..(169): Any amino acid
  MOD_RES (171)..(177): Any amino acid
  MOD_RES (179)..(180): Any amino acid
  MOD_RES (182)..(186): Any amino acid
  MOD_RES (195)..(197): Any amino acid
  MOD_RES (199)..(209): Any amino acid
XXXXXXXXXCXXCXXXXXSKKALTEHXXXHXXXXXXXCXXCXXXXXHKNALQNHXXXHXXXXXXXCXXCXXXXXRADNLTEHXXXHXXXXXXXCXXCXXXXXDPGHLVRHXXXHXXXXXXXCXXCXXXXXRSDNLVRHXXXHXXXXXXXCXXCXXXXXRSDHLTTHXXXHXXXXXXXCXXCXXXXXTSGSLVRHXXXHXXXXXXXXXXX

SEQ ID NO: 2502 - protein, 209 aa, Artificial Sequence
  source: /note="Description of Artificial Sequence: Synthetic polypeptide"
  MOD_RES (1)..(9): Any amino acid
  MOD_RES (11)..(12): Any amino acid
  MOD_RES (14)..(18): Any amino acid
  MOD_RES (27)..(29): Any amino acid
  MOD_RES (31)..(37): Any amino acid
  MOD_RES (39)..(40): Any amino acid
  MOD_RES (42)..(46): Any amino acid
  MOD_RES (55)..(57): Any amino acid
  MOD_RES (59)..(65): Any amino acid
  MOD_RES (67)..(68): Any amino acid
  MOD_RES (70)..(74): Any amino acid
  MOD_RES (83)..(85): Any amino acid
  MOD_RES (87)..(93): Any amino acid
  MOD_RES (95)..(96): Any amino acid
  MOD_RES (98)..(102): Any amino acid
  MOD_RES (111)..(113): Any amino acid
  MOD_RES (115)..(121): Any amino acid
  MOD_RES (123)..(124): Any amino acid
  MOD_RES (126)..(130): Any amino acid
  MOD_RES (139)..(141): Any amino acid
  MOD_RES (143)..(149): Any amino acid
  MOD_RES (151)..(152): Any amino acid
  MOD_RES (154)..(158): Any amino acid
  MOD_RES (167)..(169): Any amino acid
  MOD_RES (171)..(177): Any amino acid
  MOD_RES (179)..(180): Any amino acid
  MOD_RES (182)..(186): Any amino acid
  MOD_RES (195)..(197): Any amino acid
  MOD_RES (199)..(209): Any amino acid
XXXXXXXXXCXXCXXXXXTSGSLVRHXXXHXXXXXXXCXXCXXXXXQSSNLVRHXXXHXXXXXXXCXXCXXXXXRNDALTEHXXXHXXXXXXXCXXCXXXXXQRAHLERHXXXHXXXXXXXCXXCXXXXXTTGNLTVHXXXHXXXXXXXCXXCXXXXXRADNLTEHXXXHXXXXXXXCXXCXXXXXRSDNLVRHXXXHXXXXXXXXXXX

SEQ ID NO: 2503 - protein, 209 aa, Artificial Sequence
  source: /note="Description of Artificial Sequence: Synthetic polypeptide"
  MOD_RES (1)..(9): Any amino acid
  MOD_RES (11)..(12): Any amino acid
  MOD_RES (14)..(18): Any amino acid
  MOD_RES (27)..(29): Any amino acid
  MOD_RES (31)..(37): Any amino acid
  MOD_RES (39)..(40): Any amino acid
  MOD_RES (42)..(46): Any amino acid
  MOD_RES (55)..(57): Any amino acid
  MOD_RES (59)..(65): Any amino acid
  MOD_RES (67)..(68): Any amino acid
  MOD_RES (70)..(74): Any amino acid
  MOD_RES (83)..(85): Any amino acid
  MOD_RES (87)..(93): Any amino acid
  MOD_RES (95)..(96): Any amino acid
  MOD_RES (98)..(102): Any amino acid
  MOD_RES (111)..(113): Any amino acid
  MOD_RES (115)..(121): Any amino acid
  MOD_RES (123)..(124): Any amino acid
  MOD_RES (126)..(130): Any amino acid
  MOD_RES (139)..(141): Any amino acid
  MOD_RES (143)..(149): Any amino acid
  MOD_RES (151)..(152): Any amino acid
  MOD_RES (154)..(158): Any amino acid
  MOD_RES (167)..(169): Any amino acid
  MOD_RES (171)..(177): Any amino acid
  MOD_RES (179)..(180): Any amino acid
  MOD_RES (182)..(186): Any amino acid
  MOD_RES (195)..(197): Any amino acid
  MOD_RES (199)..(209): Any amino acid
XXXXXXXXXCXXCXXXXXRSDNLVRHXXXHXXXXXXXCXXCXXXXXRSDHLTTHXXXHXXXXXXXCXXCXXXXXTSGSLVRHXXXHXXXXXXXCXXCXXXXXQSSNLVRHXXXHXXXXXXXCXXCXXXXXRNDALTEHXXXHXXXXXXXCXXCXXXXXQRAHLERHXXXHXXXXXXXCXXCXXXXXTTGNLTVHXXXHXXXXXXXXXXX

SEQ ID NO: 2504 - protein, 209 aa, Artificial Sequence
  source: /note="Description of Artificial Sequence: Synthetic polypeptide"
  MOD_RES (1)..(9): Any amino acid
  MOD_RES (11)..(12): Any amino acid
  MOD_RES (14)..(18): Any amino acid
  MOD_RES (27)..(29): Any amino acid
  MOD_RES (31)..(37): Any amino acid
  MOD_RES (39)..(40): Any amino acid
  MOD_RES (42)..(46): Any amino acid
  MOD_RES (55)..(57): Any amino acid
  MOD_RES (59)..(65): Any amino acid
  MOD_RES (67)..(68): Any amino acid
  MOD_RES (70)..(74): Any amino acid
  MOD_RES (83)..(85): Any amino acid
  MOD_RES (87)..(93): Any amino acid
  MOD_RES (95)..(96): Any amino acid
  MOD_RES (98)..(102): Any amino acid
  MOD_RES (111)..(113): Any amino acid
  MOD_RES (115)..(121): Any amino acid
  MOD_RES (123)..(124): Any amino acid
  MOD_RES (126)..(130): Any amino acid
  MOD_RES (139)..(141): Any amino acid
  MOD_RES (143)..(149): Any amino acid
  MOD_RES (151)..(152): Any amino acid
  MOD_RES (154)..(158): Any amino acid
  MOD_RES (167)..(169): Any amino acid
  MOD_RES (171)..(177): Any amino acid
  MOD_RES (179)..(180): Any amino acid
  MOD_RES (182)..(186): Any amino acid
  MOD_RES (195)..(197): Any amino acid
  MOD_RES (199)..(209): Any amino acid
XXXXXXXXXCXXCXXXXXDPGHLVRHXXXHXXXXXXXCXXCXXXXXRSDNLVRHXXXHXXXXXXXCXXCXXXXXRSDHLTTHXXXHXXXXXXXCXXCXXXXXTSGSLVRHXXXHXXXXXXXCXXCXXXXXQSSNLVRHXXXHXXXXXXXCXXCXXXXXRNDALTEHXXXHXXXXXXXCXXCXXXXXQRAHLERHXXXHXXXXXXXXXXX

SEQ ID NO: 2505 - protein, 209 aa, Artificial Sequence
  source: /note="Description of Artificial Sequence: Synthetic polypeptide"
  MOD_RES (1)..(9): Any amino acid
  MOD_RES (11)..(12): Any amino acid
  MOD_RES (14)..(18): Any amino acid
  MOD_RES (27)..(29): Any amino acid
  MOD_RES (31)..(37): Any amino acid
  MOD_RES (39)..(40): Any amino acid
  MOD_RES (42)..(46): Any amino acid
  MOD_RES (55)..(57): Any amino acid
  MOD_RES (59)..(65): Any amino acid
  MOD_RES (67)..(68): Any amino acid
  MOD_RES (70)..(74): Any amino acid
  MOD_RES (83)..(85): Any amino acid
  MOD_RES (87)..(93): Any amino acid
  MOD_RES (95)..(96): Any amino acid
  MOD_RES (98)..(102): Any amino acid
  MOD_RES (111)..(113): Any amino acid
  MOD_RES (115)..(121): Any amino acid
  MOD_RES (123)..(124): Any amino acid
  MOD_RES (126)..(130): Any amino acid
  MOD_RES (139)..(141): Any amino acid
  MOD_RES (143)..(149): Any amino acid
  MOD_RES (151)..(152): Any amino acid
  MOD_RES (154)..(158): Any amino acid
  MOD_RES (167)..(169): Any amino acid
  MOD_RES (171)..(177): Any amino acid
  MOD_RES (179)..(180): Any amino acid
  MOD_RES (182)..(186): Any amino acid
  MOD_RES (195)..(197): Any amino acid
  MOD_RES (199)..(209): Any amino acid
XXXXXXXXXCXXCXXXXXRSDHLTTHXXXHXXXXXXXCXXCXXXXXTSGSLVRHXXXHXXXXXXXCXXCXXXXXQSSNLVRHXXXHXXXXXXXCXXCXXXXXRNDALTEHXXXHXXXXXXXCXXCXXXXXQRAHLERHXXXHXXXXXXXCXXCXXXXXTTGNLTVHXXXHXXXXXXXCXXCXXXXXRADNLTEHXXXHXXXXXXXXXXX

SEQ ID NO: 2506 - protein, 209 aa, Artificial Sequence
  source: /note="Description of Artificial Sequence: Synthetic polypeptide"
  MOD_RES (1)..(9): Any amino acid
  MOD_RES (11)..(12): Any amino acid
  MOD_RES (14)..(18): Any amino acid
  MOD_RES (27)..(29): Any amino acid
  MOD_RES (31)..(37): Any amino acid
  MOD_RES (39)..(40): Any amino acid
  MOD_RES (42)..(46): Any amino acid
  MOD_RES (55)..(57): Any amino acid
  MOD_RES (59)..(65): Any amino acid
  MOD_RES (67)..(68): Any amino acid
  MOD_RES (70)..(74): Any amino acid
  MOD_RES (83)..(85): Any amino acid
  MOD_RES (87)..(93): Any amino acid
  MOD_RES (95)..(96): Any amino acid
  MOD_RES (98)..(102): Any amino acid
  MOD_RES (111)..(113): Any amino acid
  MOD_RES (115)..(121): Any amino acid
  MOD_RES (123)..(124): Any amino acid
  MOD_RES (126)..(130): Any amino acid
  MOD_RES (139)..(141): Any amino acid
  MOD_RES (143)..(149): Any amino acid
  MOD_RES (151)..(152): Any amino acid
  MOD_RES (154)..(158): Any amino acid
  MOD_RES (167)..(169): Any amino acid
  MOD_RES (171)..(177): Any amino acid
  MOD_RES (179)..(180): Any amino acid
  MOD_RES (182)..(186): Any amino acid
  MOD_RES (195)..(197): Any amino acid
  MOD_RES (199)..(209): Any amino acid
XXXXXXXXXCXXCXXXXXRSDHLTTHXXXHXXXXXXXCXXCXXXXXDPGNLVRHXXXHXXXXXXXCXXCXXXXXRRDELNVHXXXHXXXXXXXCXXCXXXXXQLAHLRAHXXXHXXXXXXXCXXCXXXXXERSHLREHXXXHXXXXXXXCXXCXXXXXRSDKLVRHXXXHXXXXXXXCXXCXXXXXTKNSLTEHXXXHXXXXXXXXXXX

SEQ ID NO: 2507 - protein, 209 aa, Artificial Sequence
  source: /note="Description of Artificial Sequence: Synthetic polypeptide"
  MOD_RES (1)..(9): Any amino acid
  MOD_RES (11)..(12): Any amino acid
  MOD_RES (14)..(18): Any amino acid
  MOD_RES (27)..(29): Any amino acid
  MOD_RES (31)..(37): Any amino acid
  MOD_RES (39)..(40): Any amino acid
  MOD_RES (42)..(46): Any amino acid
  MOD_RES (55)..(57): Any amino acid
  MOD_RES (59)..(65): Any amino acid
  MOD_RES (67)..(68): Any amino acid
  MOD_RES (70)..(74): Any amino acid
  MOD_RES (83)..(85): Any amino acid
  MOD_RES (87)..(93): Any amino acid
  MOD_RES (95)..(96): Any amino acid
  MOD_RES (98)..(102): Any amino acid
  MOD_RES (111)..(113): Any amino acid
  MOD_RES (115)..(121): Any amino acid
  MOD_RES (123)..(124): Any amino acid
  MOD_RES (126)..(130): Any amino acid
  MOD_RES (139)..(141): Any amino acid
  MOD_RES (143)..(149): Any amino acid
  MOD_RES (151)..(152): Any amino acid
  MOD_RES (154)..(158): Any amino acid
  MOD_RES (167)..(169): Any amino acid
  MOD_RES (171)..(177): Any amino acid
  MOD_RES (179)..(180): Any amino acid
  MOD_RES (182)..(186): Any amino acid
  MOD_RES (195)..(197): Any amino acid
  MOD_RES (199)..(209): Any amino acid
XXXXXXXXXCXXCXXXXXRKDNLKNHXXXHXXXXXXXCXXCXXXXXRSDHLTTHXXXHXXXXXXXCXXCXXXXXDPGNLVRHXXXHXXXXXXXCXXCXXXXXRRDELNVHXXXHXXXXXXXCXXCXXXXXQLAHLRAHXXXHXXXXXXXCXXCXXXXXERSHLREHXXXHXXXXXXXCXXCXXXXXRSDKLVRHXXXHXXXXXXXXXXX

SEQ ID NO: 2508 - RNA, 2645 nt, Artificial Sequence
  source: /note="Description of Artificial Sequence: Synthetic polynucleotide"
aggaaauaagagagaaaagaagaguaagaagaaauauaagagccaccauggccccgaagaaaaagaggaaggucgggauccacggagucccagccgcaggaagcagcggaagccuggaacccggagaaaaacccuacaagugcccagaaugcggcaagagcuucagccgcagcgaccaccugaccaaccaccagagaacccacaccggagaaaagccauacaaaugcccagagugcgggaaaagcuucagcacaagcggcagccucgucaggcaccagcggacacacaccggcgagaagcccuacaagugcccggaaugcggaaagagcuucagccaagccggacaccucgccagccaccagaggacccacacaggagagaaaccguacaaaugcccggagugcggcaagagcuucagccggagcgacaagcugaccgaacaccagcgaacccacacgggcgaaaagccguacaagugccccgagugcggaaaaagcuucagcacgagcggaaaccucaccgagcaccagcgcacccacacgggagagaagccguacaagugccccgaaugcggaaagagcuucagccagagcagcaaccucgugcgccaccaacggacgcacacaggggaaaagcccuacaagugcccggaaugcggcaaaagcuucagcacccaccuggaccugauccggcaccaacgcacgcacaccggggaaaaaccgaccggaaaaaagaccagcgcgagcggaagcggaggaggaagcggaggcgacgcccuggacgacuucgaccuggacaugcuggggagcgacgcacuggacgacuucgaccuggacaugcugggaagcgacgcgcuggacgacuucgaccuggacaugcugggcagcgacgcccucgacgacuucgaccucgacaugcugagcggcggacccaagaagaagagaaaggucggaagccaguaccucccggacaccgacgacaggcaccgcaucgaagagaagcggaaaagaaccuacgaaaccuucaagagcaucaugaaaaagagcccguucagcggaccaaccgaccccagaccaccaccgagaagaaucgcggucccaagcaggagcagcgccagcgucccgaagccagccccacagccguaccccuucaccagcagccugagcaccaucaacuacgacgaguuccccaccaugguguucccgagcggccagauaagccaggccagcgcacuggcaccagccccaccgcaagugcugccccaagcacccgcaccagcacccgcccccgcgauggucagcgcccuggcacaagccccagccccagucccggugcucgcaccaggaccaccccaagcagucgcaccgccagccccaaagccgacccaagccggagaaggcacccucagcgaggcgcuccugcaacuccaauucgacgacgaggaccugggagcccugcugggcaacagcaccgacccggcaguguucaccgaccuggccagcguggacaacagcgaauuccagcagcuccugaaccaaggaaucccagucgcgccacacaccaccgagccgaugcugauggaauacccagaagcgaucacgagacuggucaccggggcccaaagaccgccggacccagcgccagcaccacugggagccccaggacugcccaacggacugcucagcggcgacgaggacuucagcagcaucgcggacauggacuucagcgcacuccucggaagcggaagcggcagcagagacagccgggaaggaauguuccuccccaagccagaagccggaagcgcaaucagcgacguguucgaaggacgggaagucugccagccgaagcgccucagaccguuccacccaccgggaagcccaugggccaacagaccgcugccagccagccuggcaccgaccccaaccggaccaguccacgaaccagucggcagccugacaccagcaccagugccccagccacuggacccagcaccggcagugaccccagaagccagccaccuccuggaggaccccgacgaagaaaccagccaggccgugaaggcccugagggagauggccgacacggugaucccacagaaggaagaagcagcgaucugcggccaaauggaccucagccacccaccgccaagaggccaccuggacgagcucaccaccacccuggaaagcaugaccgaggaccucaaccucgacagcccccugacaccggagcucaacgagauccuggacaccuuccucaacgacgaaugccugcuccacgccaugcacaucagcaccggacugagcaucuucgacaccagccuguucagcgggggaaaacgaccggcagccaccaaaaaggccggacaggcgaagaagaagaaggggagcuacccguacgacgugcccgacuacgccugagcggccgcuuaauuaagcugccuucugcggggcuugccuucuggccaugcccuucuucucucccuugcaccuguaccucuuggucuuugaauaaagccugaguaggaagucuagaaaaaaaaaaaaaaaaaaaaaaaaaaaaaaaaaaaaaaaaaaaaaaaaaaaaaaaaaaaaaaaaaaaaaaaaaaaaaaaaaaaaaaaaaaaaaaaaaaaaaaaaaaaaaaaaaa

SEQ ID NO: 2509 - RNA, 627 nt, Artificial Sequence
  source: /note="Description of Artificial Sequence: Synthetic polynucleotide"
cuggaacccggagaaaaacccuacaagugcccagaaugcggcaagagcuucagccgcagcgaccaccugaccaaccaccagagaacccacaccggagaaaagccauacaaaugcccagagugcgggaaaagcuucagcacaagcggcagccucgucaggcaccagcggacacacaccggcgagaagcccuacaagugcccggaaugcggaaagagcuucagccaagccggacaccucgccagccaccagaggacccacacaggagagaaaccguacaaaugcccggagugcggcaagagcuucagccggagcgacaagcugaccgaacaccagcgaacccacacgggcgaaaagccguacaagugccccgagugcggaaaaagcuucagcacgagcggaaaccucaccgagcaccagcgcacccacacgggagagaagccguacaagugccccgaaugcggaaagagcuucagccagagcagcaaccucgugcgccaccaacggacgcacacaggggaaaagcccuacaagugcccggaaugcggcaaaagcuucagcacccaccuggaccugauccggcaccaacgcacgcacaccggggaaaaaccgaccggaaaaaagaccagc

SEQ ID NO: 2510 - protein, 1713 aa, Artificial Sequence; identical to SEQ ID NO: 180
  source: /note="Description of Artificial Sequence: Synthetic polypeptide"

SEQ ID NO: 2511 - DNA, 20 bp, Homo sapiens
aactgaacatcggtgagtta

SEQ ID NO: 2512 - DNA, 20 bp, Homo sapiens
tggtttctggctgacacccg

SEQ ID NO: 2513 - DNA, 20 bp, Homo sapiens
atggttaatcggtcccccgc

SEQ ID NO: 2514 - DNA, 20 bp, Homo sapiens
gtcctctgggaagatctgct

SEQ ID NO: 2515 - DNA, 20 bp, Homo sapiens
ggtttgaaaggaaggcagag

SEQ ID NO: 2516 - DNA, 20 bp, Homo sapiens
accctgggcgcccaccccga

SEQ ID NO: 2517 - DNA, 20 bp, Homo sapiens
tcggggtgggcgcccagggt

SEQ ID NO: 2518 - DNA, 20 bp, Homo sapiens
ttctccctgcctccacgccg

SEQ ID NO: 2519 - DNA, 147 bp, Homo sapiens
actgcgggggaactggaagggagctcccagaacaaggatccagaagattggcatctggggcctgggatttaggtttctaaatcgtgggccatggggcagccttatctctgcaaaagcattgagggtagaagtcaatgatttgggaag

SEQ ID NO: 2520 - DNA, 174 bp, Homo sapiens
tattgaattaggggatctcggaggtaggctgtcagtgcctgatagtatcagttagaatgcctgacttggggtgacaatggcttggaggggtgggtgagtcaagggtcaaatgagtgcccgtgagtcatgatgcctgccttgtacaattgataactgaacatcggtgagttaggg

SEQ ID NO: 2521 - DNA, 20 bp, Homo sapiens
gtgggtgagtcaagggtcaa

SEQ ID NO: 2522 - DNA, 18 bp, Homo sapiens
cccagcagttgtaattag

SEQ ID NO: 2523 - DNA, 167 bp, Homo sapiens
accccgggtgtcagccagaaaccaacaaacagccaaatccctgcagccccgcccagcctatccaccggcgggggaccgattaaccattaacccccacccctccccggcagagcctccaccccttcacagaggctaggccaagactcccagcagatcttcccagagga

SEQ ID NO: 2524 - DNA, 20 bp, Homo sapiens
cagggatttggctgtttgtt

SEQ ID NO: 2525 - DNA, 117 bp, Homo sapiens
ggtttgaaaggaaggcagagagggcactgggaggaggcagtgggagggcggagggcgggggccttcggggtgggcgcccagggtagggcaggtggccgcggcgtggaggcagggaga
